United States Patent Application Publication US 2026/0068890 A1 - sequence listing, part 3

SEQ ID NO: 211 - DNA, 952 bp, Priestia aryabhattai
  source 1..952: mol_type = genomic DNA
ctccagaagaatttaagaagcgcattttactttctacaaccattgagggggaagagaaagagcgttatttcttagtaggtgacattgcagcgagtcaattgctggctaataatcacattaataaattacataataaaattacaagtcatattccatacatcacttttttagctgccattgcgtattaccatgcgttacatgcaaaagataaaaaagacaatacaattgaaattgactatttttctaccatgttaccaatctggctccttaagaaagagagcacatttggggcggctcaaaaagctatggccaatcgcttcttaggcgaccattcgtttaccgtgcatacacctggttttgaaaatacgttaaaggtattagtagaagaaagtgcgtgcttaaaagagggagaaagtgcacgttttgcgttaaaaaaagacttaacgcttcaagatcgtgaagatgcgaatgaatatgtagaatgtgaaacagtcatggttgacataggcggcggctccattgatgtggttattttaccagaagggttgaaagctgccaatagccgtgaatcgttccaaagcattgaaggtattccttatttagctcatattgataaattgcgtaaagagaaatttctagaattatttacagacttacgtgcctttgatcaatttattctcgataactacagcaagcaaaagtttgtattaaaaaacgagaatacaggtgaatcgattgatttaacaagtacaataaaatcttcactacgagaatatgtggagattttattagctaaattaaatgacgtcgcaccaccaccagcgaataaactacgtaagtatgtatactgcggcggagtagctcccactttagaagtagctatcatgaatagtatgcgtgagaaaattggagaagaacgtacggagaagtatcataaggttccccaagatag

SEQ ID NO: 212 - DNA, 910 bp, Priestia aryabhattai
  source 1..910: mol_type = genomic DNA
gaaaagaaaaactcctcatagagattgatcttcgcttgcattttctgttctgaatactgattgcgttgtatttcgatccaaaaaggagatcctttaaaaatacaaaacagatccggttcaatccctccttttcgtccgatgggcttatcttcgacaatgacctgtttaggtgtgctatacgtacacatttgtttatagacatccaagatagaaaggaaatgtaatattttttgagagttcttttttatctttgcatccacgggcaaatagacggtcggagaatactgctgtgtacgttcaattacccctaatcgatataaacgtatcattacactattacatgcatttacgggcgatttcagctgtttaaagaagaggtcaactaatgagtctcgatccacggctctaaattcattaataaacgctatgatgtctttatcacgttgagataaacggaaactcatcgctgctcctccttctctaatagcccaaagatggactgtgacaccacttctagttctggctcaggatctttcacgagcgttttataaggtgaaagtatttccttacaagctccttcatctaagaagtaggcttgaaactctttcacttcatcaattttaattttcatacgccccctggctgtggcatcaatttcttctgctcctatcactccggctactttcgcattggttgcatcagcctgcctaccagagattcttacccgtaagttggcctttaatgcggagtttaataaatctgcatcgggacgctgcatggcaataatcgtatgaactcctaacgcacgaccctggctcgcaaactgttgaatcatctctacaagctccgtttctctctttactatgctcatttcatcaattaccacaacgatacgaggcagcttaaaagg

SEQ ID NO: 213 - DNA, 858 bp, Priestia aryabhattai
  source 1..858: mol_type = genomic DNA
agagaagagcataaggggtttttgcccccaccataggtgtggggctaggcagagcctagcaaaaccgtgggtacaaagaaaatcgctaaatgtctcctttaagtcccctttttttagcgtacgtccctttcaagtccccctttaaaattccaatgtcccctttatgtctccctattttgaagccatgtcccctttgcgtccccctctgttttttcacttcatgaccaaatcctcttctttttcattcaacttttttggcttttcttgaaaaattttttgttcatcttcatagagctgaatgttttcatcgctggactgaatcgtatctttttaatcgcaatttttgattctgtctcgacttttccatagcttttcattttcttttttataaaatctttttctaactcatgtgaacataaaaaaaataaatatcaacatcttgtgaacgtttatttttttagaacggtaatcttttatagaataaaaatggattcataaatcataaaaaaacatgcgtaaattccttgtagagtaagcaaaagggaatggactttttgaccatgaacgtgcgaaaaaaataataaaagatcgtttgcttttgtcttattttttcaaaaaacacttcaaaatgaagtgacccttgaggggacattcatcaactatgaagggtcggcgaaggggttcctagcacaattattgtaatcgctgaggggcccgtgaagggactcccccttaatttgagggtacgttgagggggttccttgaagattttgcatgatatcatgtttttgctaggctctgcctagcctatcacactctgtgatagcaaaaaccccttatgctcttctctctattttt

SEQ ID NO: 214 - DNA, 841 bp, Priestia aryabhattai
  source 1..841: mol_type = genomic DNA
caccgtaaactgatcggttccattaaaattcagatttggctgatagctaaaggttccattggtatttactgccgccactccgttggttggcgcagcttgcagctgataactaagaggatttccatctacatctgtccctactatggctcctattattgggctatcttcttgtgtgctgaacgtgtagtttggcaccgttggtgcatcattcactggcgtgacaatcaccgtcaccgtggaaacggtcgttcctccctgaccgtctgataccaatacggtaaattgatcggttccattaaaattcggatttggctgataactaaaggttccatctgcatttaccacggctaccccgttgccaggcgcagcttgcaaactaaacgttaataaatctccatctgggtctaccgccacgatttgattgattaacgtgctgtcttccgcaatggtaaaactgacattggatgtaattggaggatcatttactggtatgacattgatggttaccgtggaaacggccgttcctccctggccatctgataccaacaccgtaaactgatcggttccattaaaatttagatttggctggtagctaaaagttccattggcattcactacagctattccatttgttggcctgttttgcagctgataactaagaggatttccatctacatctgtccctactatggctcctactacaggactgtcttcctgcgtactgaacgtgtagtttggcaccgttggtgcatcattcaccggcgtaatagtgaccgtcaccgtggaaacagctgttcctccctgaccatctgataccagcaccgtaaactgatcggttccg

SEQ ID NO: 215 - DNA, 641 bp, Priestia aryabhattai
  source 1..641: mol_type = genomic DNA
agttaagtcgggtaagcgaggggcatcactgcccctgactcccctaagaaccgtacgtgagcctttcaactcatacggctcaagcctcccattgcaggtccatttgctgtcgtatcttcatcacataccgtattggtaagtaaaacgtacgccgacgctccaaatggaggtatacataacagtacgtttctttcgtcaaaagatagccacaaccttatattcctacgagagaccaacgagaagtcagctccctttcgggcctatcatggatttgtccgtaaggacgatagtatccgtccagttatacagtttcctgctttcctgttctctttcgagataacggcattcgctttctctcgtatcctttaccctctgtcacatcgtttgactttacagtcatcctactgtttacacagatgacaaagggcttaccaagttccgcatcttatagatacaacgaggttaggtgggttctttactccgggcaagatacgggacgcgtcacagcagctttatgaatctgcttttcctcttgccaatacccaggcaaatctgtgcactatcctgagctaatcctgacgaagcttacaaaccttcactaatgttcaccatactcatcttcccctagcagtgttccgagt

SEQ ID NO: 216 - DNA, 521 bp, Priestia aryabhattai
  source 1..521: mol_type = genomic DNA
attggatagagcgtttgactacggatcaaaaggttaggggttcgactcctctcgggcgcgccatgaacgggaagtagctcagcttggtagagcacttggtttgggaccaaggggtcgcaggttcgaatcctgtcttcccgaccagagaagtatcatggggccttagctcagctgggagagcgcctgccttgcacgcaggaggtcagcggttcgatcccgctaggctccaccatataatatacggaggaatacccaagtccggctgaagggatcggtcttgaaaaccgacaggggtgttaaagcccgcgggggttcgaatccctcttcctccgccattttaattttatatcttggtcccgtggtgtagcggttaacatgcctgcctgtcacgcaggagatcgcgggttcgattcccgtcgggaccgccatttttaaagataagcgggtgtagtttaatggtaaaacctcagccttccaagctgatgtcgtgagttcgattctcatcacccgctccaaataat

SEQ ID NO: 217 - DNA, 466 bp, Priestia aryabhattai
  source 1..466: mol_type = genomic DNA
taccgtaaactgatcggttccattaaaattcagatttggctgatagctaaaggttccgtccgcattcactgtcgccactccgttggttggcgcaacttgcaactgataactaagaggatttccatctacatctgtccctactatagctcctactacaggactgtcttcctgcgtactgaatgtgtagtttggcaccgttggtgcatcattcaccggcgtaacagtgactgtcaccgtggaaacagctgttcctccttgaccatctgataccagtaccgtaaattgatcggttccattaaaattcagatttggctggtagttaaaggttccattggcattcactacggctactccgttgccaggtgccgtttgcagactaaaggttaatgaatctccatctgggtctaccgccacgatttgattgattaacgtactgtcttccgcaatggtaaaactgacattggac

SEQ ID NO: 218 - DNA, 421 bp, Priestia aryabhattai
  source 1..421: mol_type = genomic DNA
tcacgtacggttcttaggggggtgggcgctcgtgagagtgcctgcctacccgacttaattaaggttttatatgctatatatagatttgaataatgaaagggggacaagctttaatgattgaagagggttatggacattggcatgtagactattataacgaagaactagatttctatactacggcagccggattttacaatgatagaggaacttgggaagtgttttttgatgaatatgaaacagaggacttatataaaatcttaggttcaaattgcaacatcgataaagatttaggtgttcttctatttacagcaattgactacaatgatgctcaagaaaagttcttaagatgggtagagactgtattaattccttatgttaaagtaagtccaaacttaaagataaaaggtacctagaagcc

SEQ ID NO: 219 - DNA, 385 bp, Priestia aryabhattai
  source 1..385: mol_type = genomic DNA
gtttgttggcctgttttgcagctgataactaagaggatttccatctacatctgtccctactatggctcctactacaggactgtcttcctgcgtactgaatgtgtagtttggcaccgttggtgcatcattcaccggcgtaacagtgactgtcaccgtggaaacggccgttcctccctgaccatctgataccagcaccgtaaattgatcggttccgttaaaatttaaattcggttgatagttaaaggttccattgggattcactatggctactccgttgccaggtgccgtttgcagactaaacgttaataaatctccatctgggtctaccgccacaactcgattgattaacgtactgtcttccgcaatggtaaaactgacattggat

SEQ ID NO: 220 - DNA, 384 bp, Priestia aryabhattai
  source 1..384: mol_type = genomic DNA
agctgggagagcacctgccttacaagcagggggtcggcggttcgatcccgtcatcctccaccaccgtgccggtgtagctcaactggtagagcaactgacttgtaatcagtaggttgggggttcaagtcctcttgccggcaccatttatatcggaggggtagcgaagtggctaaacgcggcggactgtaaatccgctccttcgggttcggcagttcgaatctgcccccctccaccatttttattgggctatcgccaagcggtaaggcaacggattttgattccgtcatgcgttggttcgaatccagctagcccagccatagagagccattagctcagttggtagagcatctgacttttaatcagagggtcgaaggttcgagtcct

SEQ ID NO: 221 - DNA, 373 bp, Priestia aryabhattai
  source 1..373: mol_type = genomic DNA
ttaataattgtaacgaatgatatggcggtgtagctcagctggctagagcgtacggttcatacccgtgaggtcgtgggttcgactccctccgccgctaccatataagttacgtttttataaatatacggaggaatacccaagtccggctgaagggatcggtcttgaaaaccgacaggggtgtcaaagcccgcgggggttcgaatccctcttcctcctccatttatatgattatcgcggggtggagcagttcggtagctcgtcgggctcataacccgaaggtcgcaggttcaaatcctgtccccgcaaccaaagtggtcccgtggtgtagcggttaacatgcctgcctgtcacgcaggagatcgcgggttcgatt

SEQ ID NO: 222 - DNA, 370 bp, Priestia aryabhattai
  source 1..370: mol_type = genomic DNA
ccttggtcacgaatgaagatacgccagtgtccagtcaaatcacagcgtttgatccagatggagaagtgctgacgtacaccttacaagatcctccgacaaacggagtggcagtggtcaatgcggatggcaccttcacatatacgccaaatgaaaattacaatggtcctgatacgtttacagtgttaattagcgacccatcgggcgcatttatagtgacgagtgtatttgtgacggttacgccagtgaatgatgtgccagtggtgccaaactatgagtttgtaatcaatgaagacacgaccttaaatagccaagtggtggcaacggatgtcgatggcaacccattgacgtacgggttactgacaggtccagt

SEQ ID NO: 223 - DNA, 288 bp, Priestia aryabhattai
  source 1..288: mol_type = genomic DNA
aaactttaaaagcgtaagctttactcagcaaactgttacctagttttgagagaacaatctcatataaatgtctagtgataatggcaaagaggtcacacccgttcccataccgaacacggaagttaagctctttagcgccgatggtagttgggactttgtccctgtgagagtaggacatcgctaggcatttttattttgcttttttatcatcgcggggtggagcagttcggtagctcgtcgggctcataacccgaaggtcgcaggttcaaatcctgtccccgcaaccaa

SEQ ID NO: 224 - DNA, 275 bp, Priestia aryabhattai
  source 1..275: mol_type = genomic DNA
ttgattaaagaaaagtttcacttttcctcagcaattactgttatctagttttcaaagaacaattggtggagcctagcgggatcgaaccgctgacctcctgcgtgcaaggcaggcgctctcccagctgagctaaggccccattcgtttaaatatatatggtgggcctaagtggactcgaaccaccgacctcacgcttatcaggcgtgcgctctaaccagctgagctataggcccatatatatgatagagagaattctctcaaaactgaacgaaatg

SEQ ID NO: 225 - DNA, 273 bp, Priestia aryabhattai
  source 1..273: mol_type = genomic DNA
gttgacatgagacttttgatacctagtttgccatgtttcattccagtaaagtagatgttgcacaatctcagctatactattactatccttgttaggcttccataaagcttcttcttctgacaagttttcaattgaagctaaaaatggctggtaccagctagggtcattagcatttgctaacagctgatcggctaaaacatccttcgcgtgaaacatgatttccatcccctttataaaaaattcccgatctattcacaagaaaaatttaaaaaa

SEQ ID NO: 226 - DNA, 271 bp, Priestia aryabhattai
  source 1..271: mol_type = genomic DNA
attgacatgagacttttgatacctagtttgccatgtttcattccagtaaagtagatgttgcacaacctcagctatactattactatccttgttaggcttccataaagcttcttcttctgacaagttttcaattgaagctgaaaatggctggtaccagctagggtcattagcatttgctaacagctgatcggctaaaacatccttcgcgtgaaacatgatttccatcccctttataaaaaattcccgatctattcacaagaaaaatcaaaat

SEQ ID NO: 227 - DNA, 268 bp, Priestia aryabhattai
  source 1..268: mol_type = genomic DNA
ttaattattgagatacaggtctggtggcgatagcgaagaggtcacacccgttcccataccgaacacggaagttaagctctttagcgccaatggtagttgggactttgtccctgtgagagtaggacgttgccaggcaattcaataataaagacccttattagcctcttgtaaaagagcataggggttttttatttggaacattctattataagtaatgaaaataacgctattcatagcgcttatatagatttttttggaggattagctc

SEQ ID NO: 228 - DNA, 251 bp, Priestia aryabhattai
  source 1..251: mol_type = genomic DNA
ttggtatcagatggccaaggaggaacagccatttccacggtaaccatcaatgtcataccagtaaatgatcctccaattacgtctaatgtcagctttaccattgcggaagacagcacgttaatcaatcaaatcgtggcggtagacccagatggaaatccgttaacgttcagcctgcagacagcacctggcaacggagtagccgtggtgaatgccaatggaacctttaactatcagccaaatccgaattttaa

SEQ ID NO: 229 - DNA, 227 bp, Priestia aryabhattai
  source 1..227: mol_type = genomic DNA
attggatagagcgtttgactacggatcaaaaggttaggggttcgactcctctcgggcgcgccataaacgggaagtagctcagcttggtagagcacttggtttgggaccaaggggtcgcaggttcgaatcctgtcttcccgaccatttatggggccttagctcagctgggagagcgcctgccttgcacgcaggaggtcagcggttcgatcccgctaggctccaccaat

SEQ ID NO: 230 - DNA, 214 bp, Priestia aryabhattai
  source 1..214: mol_type = genomic DNA
agctgggagagcacctgccttacaagcagggggtcggcggttcgatcccgtcatcctccaccatatattatcatcgcggggtggagcagttcggtagctcgtcgggctcataacccgaaggtcgcaggttcaaatcctgtccccgcaaccaagtggtcccgtggtgtagcggttaacatgcctgcctgtcacgcaggagatcgcgggttcgatt

SEQ ID NO: 231 - DNA, 179 bp, Priestia aryabhattai
  source 1..179: mol_type = genomic DNA
taagctctttagcgccaatggtagttgggactttgtccctgtgagagtaggacgttgccaggctggaaaagatctctcttttcttttaaaaaaagttgttgacattacggtaataacttgataagatagtaaagtcgcttaagagcggcggttgaactttgaaaactgaacaaagcgac

SEQ ID NO: 232 - DNA, 175 bp, Priestia aryabhattai
  source 1..175: mol_type = genomic DNA
acaaaactttttcaaaaaagtcttgctttctttatcaaatcatgtataatataatatgtctggtggcgatagcgaagaggtcacacccgttcccataccgaacacggaagttaagctctttagcgccaatggtagttgggactttgtccctgtgagagtaggacgttgccaggct

SEQ ID NO: 233 - DNA, 167 bp, Priestia aryabhattai
  source 1..167: mol_type = genomic DNA
agctgggagagcacctgccttacaagcagggggtcggcggttcgatcccgtcatcctccaccatcgactatttaagtcagagattgcacgccggtgtagctcaattggtagagcaactgacttgtaatcagtaggttgggggttcaagtcctcttgccggcaccatt

SEQ ID NO: 234 - DNA, 167 bp, Priestia aryabhattai
  source 1..167: mol_type = genomic DNA
ttctcctagcagtattctggaccatgcatttgtcctctgtttccgcatttcctcatgcaaccgacagactcgttaccaagcatgccgtttcggatggagatcatctttgcgtctagatgagtagcgttagctacactgtaagaaagcgacttcttgtcgcaccataa

SEQ ID NO: 235 - DNA, 163 bp, Priestia aryabhattai
  source 1..163: mol_type = genomic DNA
gaggagtagtgatgttagtatgtattattacggcaaaagaaatcaagaacctttagttcaagaacaaacagaggttttggaatgtacagtagaagattgtaagggctggatgagaaaagatttctcttacgacaaccaccaaaaatgccctttgtgtggaaat

SEQ ID NO: 236 - DNA, 161 bp, Priestia aryabhattai
  source 1..161: mol_type = genomic DNA
gtaattggaggatcatttactggtatgacattgatggttactgtggaaacggccgttcctccctgaccatctgataccagtaccgtaaattgatcggttccattaaaattcagatttggctggtagctaaaggttccattggcattcactacagctattcc

SEQ ID NO: 237 - DNA, 158 bp, Priestia aryabhattai
  source 1..158: mol_type = genomic DNA
cccgtcgggaccgccatttacataaaggctcggtagctcagttggtagagcaaaggactgaaaatccttgtgtcggcggttcgattccgtcccgagccaccatcttataggggcatagtttaaaggtagaactacggtctccaaaaccgtcagtgtgg

SEQ ID NO: 238 - DNA, 158 bp, Priestia aryabhattai
  source 1..158: mol_type = genomic DNA
gcaaagatagtagaaatcttaaataactctaacacttgtccaaaccttttttattactttgcatactatagaagtgagcatcctcctgctcttccaatagatcggttcttttattactattaggttaaaaaaactactgtgtggtgaacagtagtttt

SEQ ID NO: 239 - DNA, 154 bp, Priestia aryabhattai
  source 1..154: mol_type = genomic DNA
cagaaaaaccatttacatctctttcgactttttcctcagttaataactcttgccattgtaacagtacttctaatagtcgatcttttaaattatcaaatgtttgattttcggcaattataaagcttttattattatttcctatagaaggtactgc

SEQ ID NO: 240 - DNA, 150 bp, Priestia aryabhattai
  source 1..150: mol_type = genomic DNA
ttgattaaagaaaagtttcacttttcctcagcaattactgttatctagttttcaaagaacaaaacaactgacttcaatcacatcatgataaacatcactgtgatatctacgtgcagttttgcgccgagtaatcgcaggcgcaattattaa

SEQ ID NO: 241 - DNA, 149 bp, Priestia aryabhattai
  source 1..149: mol_type = genomic DNA
cacctacacgtatacgccaaatgaaaattacaatgggatagatagctttagtgtagtagtaagcgacggccagggaggaacggcagtttctacaatcacgattacgattctgccagtaaatgatccgccagtggggccagtagtggtag

SEQ ID NO: 242 - DNA, 143 bp, Priestia aryabhattai
  source 1..143: mol_type = genomic DNA
tacctatacgtatacgccaaatgaaaattacaatgggatagatagcttcagtgtagtagtaagtgacggccagggagaaacggcagtttctacaatcacgattacgattctgccagtaaatgatccgccagtggggccagtaa

SEQ ID NO: 243 - DNA, 143 bp, Priestia aryabhattai
  source 1..143: mol_type = genomic DNA
agctgggagagcacctgccttacaagcagggggtcggcggttcgatcccgtcatcctccaccatttgccggtgtagctcaactggtagagcaactgacttgtaatcagtaggttgggggttcaagtcctcttgccggcaccag

SEQ ID NO: 244 - DNA, 141 bp, Priestia aryabhattai
  source 1..141: mol_type = genomic DNA
gacggcgattgtggcgaagtggttaacgcaccggattgtggttccggcattcgtgggttcgattcccatcagtcgccccatcttaagtaacgcgggtgtagtttagtggtaaaacctcagccttccaagctgatgtcgtga

SEQ ID NO: 245 - DNA, 141 bp, Priestia aryabhattai
  source 1..141: mol_type = genomic DNA
caggaaaattcacgccaagttcttttaatttggcttccgcttgttctttagtcagcgtgccgtcgcgaaactgatccataatagctttcgcttttttctttgtagccgcatctaaattgttaaaaggaccgcctctatgtt

SEQ ID NO: 246 - DNA, 130 bp, Priestia aryabhattai
  source 1..130: mol_type = genomic DNA
tcatggctcaccatttatattcacacgcgggtgtggcggaattggcagacgcgctagacttaggatctagtgtcttacgacgtgggggttcaagtcccttcacccgcatctttcattaatttcatatatg

SEQ ID NO: 247 - DNA, 128 bp, Priestia aryabhattai
  source 1..128: mol_type = genomic DNA
gggcctatagctcagctggttagagcgcacgcctgataagcgtgaggtcggtggttcgagtccacttaggcccaccatattccacagtagctcagtggtagagctatcggctgttaaccgatcggtcg

SEQ ID NO: 248 - DNA, 119 bp, Priestia aryabhattai
  source 1..119: mol_type = genomic DNA
tgagctacgggcgcttattaaaatggtgccgagggccggacttgaaccggcacggtagtcacctaccgcaggattttaagtcctgtgtgtctgccaattccaccaccccggcaggactt

SEQ ID NO: 249 - DNA, 118 bp, Priestia aryabhattai
  source 1..118: mol_type = genomic DNA
acttccgtgttcggtatgggaacgggtgtgacctcttcgctatcgccaccagacaagagattgttctctcaaaactaggtaacagtctgctgagtaaagcttacgcttttaaaagttt

SEQ ID NO: 250 - DNA, 117 bp, Priestia aryabhattai
  source 1..117: mol_type = genomic DNA
ttgattaaagaaaagtttcacttttcctcagcaattactgttatctagttttcaaagaacaatcgcaaccaaaattcttcttattagataagaagaaagtagtgtgctttctataat

SEQ ID NO: 251 - DNA, 115 bp, Priestia aryabhattai
  source 1..115: mol_type = genomic DNA
ctgtgctaattaaataaaaatggcggagagcaagggatttgaacccttgagacagcgttaaccgcctacacgatttccaatcgtgctccttcggccactcggacagctctccaaa

SEQ ID NO: 252 - DNA, 113 bp, Priestia aryabhattai
  source 1..113: mol_type = genomic DNA
ttaaaatggtggctcgggacggaatcgaaccgccgacacaaggattttcagtcctttgctctaccaactgagctaccgagccttattaaatttaaaatggcggtcccgacggg

SEQ ID NO: 253 - DNA, 112 bp, Priestia aryabhattai
  source 1..112: mol_type = genomic DNA
tggcccgttggtcaagcggttaagacaccgccctttcacggcggtaacacgggttcgaatcccgtacgggtcaccatttatttttatctacataatagtggaggattagctc

SEQ ID NO: 254 - DNA, 112 bp, Priestia aryabhattai
  source 1..112: mol_type = genomic DNA
gagctaatcctccaaaaacatctatataagcgccttgataagcgttattttcattacttatgatagaatatttcaaataaaaaacccctatgctcttttacaagagactcat
